United States Patent Application Publication US 2012/0023611 A1 - sequence listing, part 6

SEQ ID NO: 22407 - DNA, 455 bp, Zea mays
  Coding DNA Sequence Number=SeqID_8004
cttgatcttagccagaaggtccagaagccataaggagttactatgaacacctgggaaaggaagctttgggtccaagacccaacaaaggttgttaacacaggttatgtcatttagaaaatactgcagccatgaaattaaaagacacttaccccttggaagaaaagttatgaccaacctagacagcatattgaaaagcagagacattattttgccaacaaaggtccgtctagtcaaggctatggttttcccagtagtcatgtatggatgtgagagttggactataaaaaagctgagtgccgaataattgatgcttttgaactgtggtgttggagaagactcttgagagtcccttggactgcaaggagatccatccagtccatcctaaaggagatcagtcctgggtgttcactggaaggactgacgtttaagctgaaactccaatactttagccacct

SEQ ID NO: 22408 - DNA, 517 bp, Zea mays
  misc_feature (114)..(114): n is a, c, g, or t
  misc_feature (340)..(340): n is a, c, g, or t
  misc_feature (345)..(345): n is a, c, g, or t
  misc_feature (353)..(353): n is a, c, g, or t
  misc_feature (362)..(362): n is a, c, g, or t
  misc_feature (371)..(371): n is a, c, g, or t
  misc_feature (452)..(452): n is a, c, g, or t
  Coding DNA Sequence Number=SeqID_8005
gcggcgctggaggaaatcccgtggggtgaggctggcgctgagtatgtcgtggagtccaccggcgtcttcactgacaaggacaagggtgctgcacatctcaaggggggggccaanaagggggtgatctctgccccaagcaaagatgcgccggtgggggtggttggggtcaatgaggacaagtacacctcggatgtgaacattgtgtccaatgcgagctgcgccacaaactgccttgctccccttgctaaggtgattcatgacaacttcggcattgtggaggggttgatgacaactgtgcatgccatcactgcgacacagaaaactgtggacggaccctcanccaangactgganatgtggganggctgccanctttaacatcattcctagcagcaccggtgctgccaaggcggtggggaaaggtcttcctgatctgaatggggagctcactgngatgtgcttccgtgtgcctactgtgggtggctcgggtgtggacctcaccgtgagaatcgaaaagg

SEQ ID NO: 22409 - DNA, 488 bp, Zea mays
  Coding DNA Sequence Number=SeqID_8006
tccattgagttggtgatgccatccaaccatctcatcttctgttgtgcccttctcctcctaagatctatttttaagataaacacctttcaaacgtagactgttgatgctcagtgtttgtggctagccgttaaagacagcatgcaggttttgtctgcaggcaggatgagtgctctgtcctgctgagcccctcctggcgcccctatggccgcagggctcagctgcattgccctcattcccttggcatccttgactcccgcacatctgagcctgcagaccaagcccgtggacccaactgtggatgggggcgcacaggtgcagcaggcggtcaacatcgagtgtgtgtctgacttcacggaggcgccggtcctcaacatccagttcaggtacgggggaacctttcagaatgtgtctgtgaagctgcctatcacactcaacaagtttttccagcccacggaaatggcttctcaggatttcttccagcgctggaa

SEQ ID NO: 22410 - DNA, 494 bp, Zea mays
  Coding DNA Sequence Number=SeqID_8007
agggttccgtgcctttgtgacagactgggacaaagtgacagccacggtggccgggctgacgctgctggctgttgggatctattccgccaagaacgccacgtccgtagcagggcggtacattgaggcccggctggggaagccgtccctggtgcgggagacatctcgcatcacggtgctggaggcgctgaggcaccccatacaggtcagcaggcgcctcctcagtaaacctcaggacgcgttggagggtgttgtcctcagccccagcctggaggctcgcgtgcgggacattgccatcgccacaaggaacaccaagaagaacaaaagtctgtgccgaaatgttctgatgtacgggccacccggtacgggcaaaacgctgtttgccaagaaactggcgctgcactccggtatggactacgccatcatgacgggcggggatgtggcccccatggggcgggacggcgtgacggccatgcacaaggtcttcgactgggcca

SEQ ID NO: 22411 - DNA, 450 bp, Zea mays
  Coding DNA Sequence Number=SeqID_8008
gaaaacctgctttccttggttgccgtttcctcacaaagccactccaaacccccgtttccagaaccttttggaaactttccgcctcctcctttactcgttccgatggcgaaggaaccgatgcgcgtgctcgtcactggcgccgaagggcaaatgggatatgctcttgttcccatgattgctaggggagttatgcttggggcaaaccaccctgttattctgcacatgcttgatattccgccagcagctgaagcccttaatggggttaaaatggagttggttgatgctgcatttccttttctgaagggagtcgttgcaacaactgatgttgtggaagcgggcacttgccgtgaatgtggccgtcatggttgggggtatccccaggaaggaaggattggaaaggaaagatgttttgtttaaaaggtgttcaattaacaaaacccaagcatttgt

SEQ ID NO: 22412 - DNA, 564 bp, Zea mays
  Coding DNA Sequence Number=SeqID_8009
agttcatcagccaggacagccctgaggatatcgtcacagtgcacatcgagggcagctccggggcactgtggcgcatcagcccgccaagccgggcacagatgaagcgggagctgtataacggcacggccgacatcaccctgcgcttcacctggaacttccagagggacctggccaagggcggcagcgtggagtacaccaacgagaagcacaccctggacctggcccctaacagcactgcccggcggcagctggccagcctgctggaaggcacctcggaccagtccgtggtcatcccccacctcttccccaagtacatccgtgcccccagtgggcctgaagccaaccccgtgaagcagctgcagcccaacgaggaggctgactatctcggcgtgcgtatccagctgcgcagggagcgtgtgggcacaggggcagctggcttcctcgagtggtgggtcattgagctgcaggactgccaggccaactgcaacctactgcccatggtcatcttcagtgacaaggtcagcccgcccagcctgggcttcctggccggctatggcatcatgg

SEQ ID NO: 22413 - DNA, 522 bp, Zea mays
  Coding DNA Sequence Number=SeqID_8010
acagtggccggcttagagacgcattacagttgttcatgcagatgaggagacacggcatgcgtgctgacaattttaccgtggtgagccttctcactgcttgtgcgagcttaggtgcactgccacatggcagggctttgcacgcttcaatcgaacagaggatagtagaggaagatgtttaccttgggactgcacttttggacatgtacatgaaatgtgggagggtggatgaggcaaccgctgtgttccatcgcatgggcgaaagagatgtccacacttggactgccatgatcgcaggtcttgcgttcaatgggatgggtaagaatgctctggagtctttctgccagatgaagcgtgatggttttcagcccacgtcagttacctacattgctgttctgactgcgtgcagccactcaagtctgctcgacgaaggtcggctgcacttcaacgagatgagatcgttgcataaattacaccctcaggttgagcattatggctgcatgatagatttgctcgctcgcagcg

SEQ ID NO: 22414 - DNA, 312 bp, Zea mays
  Coding DNA Sequence Number=SeqID_8011
gaaaaagattgaggacgccattgacgcggccatcagctggttggaccccaaccagctccccgaggcggacgagttcgattccaaaatgaaggagctggagagcctttgcaaccccatcattgccaaaatgtaccagggcgcgggtgcccacatgggtggccccggcggcatggacgaggacgctccggctggaaacggtggccctggccccaagatcgaggaggtggcctaagcggattgtgtcagtttcgtgtgtctgctccagtggctggctggcccagtccctgctcgatttattgttgtcgtcccggg

SEQ ID NO: 22415 - DNA, 575 bp, Zea mays
  Coding DNA Sequence Number=SeqID_8012
acgcctccgtcgctataagtgggtggctgtcgcggtttgattcgcacggacgaattgtatcccgggcacgatgtgtctcagattttgatttgatcctgatcctgggaggcggtcctgtgttattgctgccagttaataagtcatgatatcttccgtgaggctctctcctgtgcctgcagccttctcaggttccagactacgctcaaaattaccgtcaattccatccatctccagtctcaaaccctccatatatgtggtctcctcgctgaaagcactctacctaacaccggtagatgggccgcggactgtcgatgattatagtgctcggagacagccacttgagttccgctgctctgcttctgcatgctgatgacaaggagtcagagtactcaggatggcgccagttcagccggtgaggcgcacagaggtgtgaatatcttgatctatttctgcacctgacgggagcttagatgcgatatttaacatttacaacaagaagggtctcaatgcattctcttacgcctggatcatctccacactctccctcgcctgcggctctggtatgatgcttatct

SEQ ID NO: 22416 - DNA, 385 bp, Zea mays
  Coding DNA Sequence Number=SeqID_8013
cctctgaggtcgcagatccgtccggttagacgaagccgcccgcacccatggcctccggtgagctcgcctgcacctacgccgccctcatcctcagcgacgacggcatcgccatcaccgccgagaagatcgccaccatcgtgaaggcggccaacatcaaggtcgagtcctactggccggcgctcttcgctaagctcctggagaagcgcagtgttgaggatctaatcctctccgttggatctggtggttttggtgatgtctataaggcccagctcaaggatggaaaggttgttgcaatcaagaagcttatacatgtgagtggccagggtgaccgggagtttactgcagaaatggagaccattggtaggatcaaacaccgcaatcttgt

SEQ ID NO: 22417 - DNA, 450 bp, Zea mays
  Coding DNA Sequence Number=SeqID_8014
gctggaaaaactcaacgccgccaatctgagccagattatgcgcgatctgcaaagccgtctgccgcagctgcatgggctgttttactatgatgagcagggccgctggatcgccacctccacgcgcagtgtgccagtgggcaccaacaactctgaccgtgaatatttccgctatcaccgcaacaacagccgtgacagtttgcacatcggcccggtgattcgcagccgcagcactggcgatctggttattccggtttccctgcgcgtcagcgatgccgcgcgtgatttcaaaggcatcctgttagccaccattaaagtggattatttccgccgtttttacagttactacgaactggggccgcgcgacgtgctggtactgatgctggcagacagcacggtgctttatgcccgtccgatgcccgacagctatatcggcaagagtctctccgccag

SEQ ID NO: 22418 - DNA, 498 bp, Zea mays
  Coding DNA Sequence Number=SeqID_8015
ctgagatgttcctgccgctgttcttggccatgctgtggggcgggtcgcaggctctggactcattcaagctgcaggtgcaggagttcgtgatggtgcaagaaggcctgtgcatggtcgtgccctgctccatcttctaccccaccagcggtgctcttggaagtgcaaggcaccttacagaggcctgtgggccgggacagccgcagctcccctgccaactgtacctggctcatcctgggcaggaaggagcagacggtaacggtcaggttccaaaaactgcatctggcctgtggctcagagcgcttaaccctgcgctcccccatccagccgcagatctccctgtgcgaggcacctgccagccctctgcaactgcctggaggcaacgtcaccatcacctacagctatgtcggggccagagctcccatgggccagggcttcctgctctcttacagccaagattggctgatgtgcctgcaggaggagttccagtgcctgaaccac

SEQ ID NO: 22419 - DNA, 252 bp, Zea mays
  Coding DNA Sequence Number=SeqID_8016
cacaaaagccttgggtcgcgctgggccccccccccggggcgcgcgcgcccccagggggccgggccccccccgcccggcgcgcccccccccgcccccctcgcccccccccgccacgccccccccccaccccaaatcccctgccctcccgcccctcacccccgcccccgacctagtcctactaatagcccatacatgtagttctcccattctctattttgttgtagttacataatactgctgtcgtttgggtgt

SEQ ID NO: 22420 - DNA, 484 bp, Zea mays
  Coding DNA Sequence Number=SeqID_8017
atgaaagtgatacctgctgccggtccgcagaacacagccacttccgtggccgggctgctggggtctgtcccgcgtctttttgtcaccgagcctttgttgcgtcagcgtggcgcgctggctctgctgatttttgccgcattcagcatgttgtggagttccatggttttgccgctcacggccatgtcgctttcccatacgcaaacagggctgtttagtctggctgggatagccggagcgctggcggcttccagaagtggcgcctgggctgacaggggaaccgggcagcgcgccagcggatgcgcactggctttattaacgctctcgtggctcccgatcgccttcgcgcagacttctttattattgcttgttattggcatgatcatgctggatttcgccgtgcagacggtgcatgtcatcaaccagagcatgctgattgccggcaaacccgctatcaccagccggcttatcggtgcctatatgtgtt

SEQ ID NO: 22421 - DNA, 561 bp, Zea mays
  Coding DNA Sequence Number=SeqID_8018
ccctctccgcgctggctccccccctcccactccccccctcgccccgccccccccgcgccccacgctccccgccccccggcctctcccgccttccccctccgctccccccgccccccccccccgcctcgtccccgcacccccgctccccgccccccccccccccccctccccccccccccccccgccccccctcccccccccccccctccccccgccccctcccctccccccccccccccccccccctccccccccccgcccgctcccctccgcccccctccccccccttccccccctcccccccccccccccctctcctctcccccgccccccccccctcccctccccccccgctgccgccccctcccccccccccctcggcccgtctcccctccccccccctcccccccccccccacgccccaccgccccctcccccccccctctcacccccccccaccccccccctccccctcaccctccccgccccctcccctcccccccccccccgcccccccctttcccctctcccacctctccgcacccccgctctcccccgcgc

SEQ ID NO: 22422 - DNA, 487 bp, Zea mays
  misc_feature (89)..(89): n is a, c, g, or t
  misc_feature (162)..(162): n is a, c, g, or t
  misc_feature (239)..(239): n is a, c, g, or t
  misc_feature (372)..(372): n is a, c, g, or t
  Coding DNA Sequence Number=SeqID_8019
gggagctccataccaaaattctggggacccagctcaacttcgcgggctcctcccgctacgccaccgcagcgcccaccgggggggctcanaagattggctcccttttcagcaagaagcctgcccagaagcccaagcccgctgcgggatggggcgggggtccanacatcatcgacgagctcgccaagggggatgggcctgacaggaggatctacctgccggatgggctgttggaccgggcngaggggccggagtacctcaccggagagggccctggagactatggctacgacccttttgggctgggcaagaagccagaggacttcgccaaggaccaggcctacgagctgatccatgccagatgggccatgctcngtgccgctggcgctggcatcccagagggctgcaacaaggtcggcgctaactgtgggcctgaggctggctgggtcaagaccggcgcgctgctcctggacggaacaccctcaactac

SEQ ID NO: 22423 - DNA, 445 bp, Zea mays
  Coding DNA Sequence Number=SeqID_8020
gcggattcgccagcaggaaaccaatgtcgaagcgcggcagcagcaggtcgagcaagcccgggctcagctcaacactgccgagcttaacctctcttacaccgaagtacgcgcgccgtatgacggtttcgtcaccaaacgcaacgtgcagcccggtacgctggtgcaggccggcagcgcgctgttttcgctggtatcgccggatatctggatcaccgccaacttcaaagagtcgcagctggcacgcatgaatccgggcgataaagtggagattggcgttgatgcctggccggacatgaagctggaagggcacgtcgacagcgtgcagatgggctccggctcgcgcttctctaccttcccggccgagaacgccaccggtaactacgtgaagattgtgcaacgcgtgccggtgaaaattgtgattgataaagggctcgacccgaatcat

SEQ ID NO: 22424 - DNA, 313 bp, Zea mays
  misc_feature (35)..(37): n is a, c, g, or t
  misc_feature (39)..(42): n is a, c, g, or t
  misc_feature (44)..(46): n is a, c, g, or t
  Coding DNA Sequence Number=SeqID_8021
ttccccactgcgatagctaccaaaggcccaacagnnngnnnngnnngatcaggttctggacgcccagccgttgcgaacaagccctcattcctgaccggtggagctggaccgggtgggcatctgtctggaaagcgcggcaccgaggacctcgacttcttcatcggcgacgaagctctggccgcagctggaggcgcgggctatggcatcaactacccgatcaggcatggtcagatagacaactgggaccttatggaacgcttctggtccaactcgatattcaagtacctgagagtggagcctgaggaccaccact

SEQ ID NO: 22425 - DNA, 546 bp, Zea mays
  Coding DNA Sequence Number=SeqID_8022
acgctcaccgacatcattactgtggggtaccagctgctgttcttcatcatcacagctctcctccggtgcaataaagacaacgcatttcgcaggaagaacgaattatatcataatctgcatcctaacatgtcccttgtgaattggagcatggacattatccgtcatagttgggcatagacagtcgcttgccaccatttggggacgtcgtctaggattatttgtattgatgaggattatgaaatgtggcgaagaccgaaaggatgacagaatgcacgataatgtggagaaagtagcagtttttagtattgtccatgctgtgagggtttgctctgtcagatagactgccgctgttgtgaatgcaagcgacagaaacccctcgattgaaccgatgatcataatcgggtggataatatggaaggctgggatatgtgtagaacctgctgctgatcaccagaagcttgtgttcaaaaattctccaagcaacatgagaaagaggagcgacggctggctatggaagcactctcgtcacccgaactactatgagga

SEQ ID NO: 22426 - DNA, 251 bp, Zea mays
  Coding DNA Sequence Number=SeqID_8023
agggttctgactttgttcgttgatacyccttcagcctcagggagggttctcacaccgccgtctcccacggcctgttgctkaacatccctyactatwaagcyccacacagctgggcaagccaaggagaggattagaggatkttgaagcgttatgacaatcccaagggaacttgttcccatgttthgsatgaacttgcttcgacagggattcattggccykctatrtacttggtctcatggttatggcaccca

SEQ ID NO: 22427 - DNA, 568 bp, Zea mays
  misc_feature (65)..(66): n is a, c, g, or t
  Coding DNA Sequence Number=SeqID_8024
agagtgagactgctgtttcttctgttactgatgccactttcaactgttctgggttggggcaagcnnggtcactatgcaatttgtaagataactcaggagtatcttagtgaagatgctctacttgcagttaaacaactgcttccagattctgctgaaggtgatcttgctgcagtttgttcttgggctgatgaggttcgctaccactatcgttggagtagtcctttacattatgttgacacaccagatttcaagtgcaactatgattactgcagagactgtcatgattcttatggacataagcatagatgtgttactggagcaatatacaactatacaatgcaactcaaatcagctgatacagacacttcatctgaatcaaaatataatttgactgaggcactaatgttcttgtcacattttgtgggggatgttcatcagcctctacattgtggttttattggagacctaggtggaaacaccataacagtacgttggtaccggaggaaaacaaatcttcatcatgtatgggataccatgattattgagtctgctctgaaaacattctatg

SEQ ID NO: 22428 - DNA, 598 bp, Zea mays
  Coding DNA Sequence Number=SeqID_8025
aaaccctaatctgtcaccaattgagataatcattcccccaaaatggcaattgcacgcactggagtctacgtcgatgactatttggagtatgccagcacgttgcccgctgaacttcagaggcttctcaacaccgttcgagaactcgatgaacgatcccaatctatgataaaccagaccaggcagcagacaaagtactgcatggggttctcatcacatggctctaagaagggtaatcatagttacaataacagttacgtgaatgacgatgatgatgcttccattgagaaaatgagaaaagaaattgaggcatatcaggatagtgcattgagtctatgtaccgagaaggttttgttagcacggcaagcatatgatctgatagatagccatataaaacgacttgatgaggatttaaacaactttgccgaagatttaaagcaagaagggaaaataccaccagatgaaccagcaattcttcccccattgcctatagtccctaaaactgaaaagcgcaagcccatatatggaacacctcaatcaaagagacttgattacagggatagagactgggatcgggaacgtgatagggactttgagctaa

SEQ ID NO: 22429 - DNA, 586 bp, Zea mays
  misc_feature (420)..(420): n is a, c, g, or t
  misc_feature (485)..(490): n is a, c, g, or t
  misc_feature (509)..(512): n is a, c, g, or t
  Coding DNA Sequence Number=SeqID_8026
atcgccgtagttgatgttacagacgatgagaggagttatgatgggcacacatcgggttctcttcattacgcgagcgacactttctccgaaaacatctcaaagcttgttcaggaagttaaaggcaaaggcaccctcgtcttccactgcgctctaagtcaggttcgcggcccaacttgtgctaggaagttggccaattatcttgcggagaataaggaagatgctggggtaaagaacattatggtcttagaacgcggcttcaatgggtgggaagctcctggtagagctgtttgccgctgcaccaatgttccttgcaaggagagtgagaatgcttaatcaaagacgtctttgtggttgagatggaatcatttaagcatatggtctttcttgttatatgtgaacacatttgtatacaaaaactgncgtaagatcactatggttacatcattatgtaaatcataagtaaactgaataccctgtttctgttnnnnnnatcacttaaataatgtaannnntccttggatggagtttgccaaggatgacaaagatattcattctcttcctgaacttcccgacagtatcacataac

SEQ ID NO: 22430 - DNA, 258 bp, Zea mays
  Coding DNA Sequence Number=SeqID_8027
tgaaaggcaacttcacaggaagggttccgggtccccgttcaaaagtgtccgttggggatctgacctgccgcctgaagaagcctgcaaagtatgatgatatcaaggctgcagttaaagctgctgcagagggccaaatgaaaggaatcctgcaatacacacaagaccaggttgtctccactgacttcaatggctgcacttattcctccctcttcgctgccgatgctggaattgcattgaatgaacactttgtgaagctgg

SEQ ID NO: 22431 - DNA, 447 bp, Zea mays
  Coding DNA Sequence Number=SeqID_8028
agacataactgcatcgacgaaaccagagtacccagtgattgatcggaaccctcctttcaccaaagtcgtcggcaatttcaacaccctcgactatctccgtttcaccaccatcaccggtgtttccgtcactgtcggctacctctccgggattaagcctggaatcaggggtccttcaatggtgactggtggactgattggactcatgggtggcttcatgtatgcttaccaaaactcggcgggtcgactcatgggtttcttccccaacgacgatgaggtagctcgctacaacgagaaatgattcaacttttctctctctttttgaataatatcatatttcccttctgatccttgtcctttgtgattgtgattgtagagggattctgtgactcaatttgggatgaatgttagtagacttatgtattttgtttccggattctagggcaatag

SEQ ID NO: 22432 - DNA, 339 bp, Zea mays
  Coding DNA Sequence Number=SeqID_8029
gcctgtccagaaggcccgatgaagagcccactcagacacgcggacagatggcgctctacgcacgcttcctcgccgtcgccctctcccacctatgcctgccatagacctacacccacaggcctcaccaggccccgcacctgcacctgcactccacctacctccgggctgatggcctctcgctgggcgccttctcagactatgcgtctgaagcggacctacccgctgaggaggtgatggctgtcgaggaggaggcggaggaagatgcgctgtctggaatcgcgctgcgaaagtatgtgaagcacacgctgacgaccggtttctcggcgcaccggatcaccg

SEQ ID NO: 22433 - DNA, 590 bp, Zea mays
  Coding DNA Sequence Number=SeqID_8030
aacccactgaccatcataagctaagaggccagctccacctgagctccagcttctctgaaggcgtacgggcccgtaacatctgcccttctttctcacctcatgaaaggagatatgccacaaggaactacatgacccaaagcctatggggcccttcaatgcactgatagagggggcatcaatgttccagcgatgccgactccgctttttgccaatgctccagccgagaaaggtggaaaaaacatcatgattgatttcatgatgggcagcgtttcagctagctgcttccaagactgcaactgctcccattgaacgagtgaagctgcttattcataatcccgatgagatgatcaagacgtggtatggtatcagagaacggacaatggtattgctgattgcttcaaacgtaccatcaaagatgacggtttctcttccttgaggaggaggaacactgctaatgtggattcgatacttacctactcatgatctgaactttgcgattaaagactacttcaacatgttgatcaacttccagaaggacatggacgcatactgtaaaagagaagctggcaacctgccctcatgagatgctg

SEQ ID NO: 22434 - DNA, 454 bp, Zea mays
  misc_feature (134)..(135): n is a, c, g, or t
  Coding DNA Sequence Number=SeqID_8031
agcgccttcgatctcgtaaacatgactaagagaactaataaggctggcattgttggaaaatacggtacccgttatggggctagtctgcggatgcatattaagaagatggaagttagtcttctcagcaaattttnntgcgaattttgtggaaagtatgctgttaagaggaaagctgtaggaatatggggatgcaaggactgcggtaaagtgaaagcaggcggtgcctacactttgaacactgcaagtgccgtgactgtgcggagcaccatcaggaggttgagggaacaaactgagggttgagtttttggttgatgctagttttttataaattagacatgcgatgctagtttatgttcagagaactacattgattgtattcaaagtaaactttcattttaagttttatctgaaatgaccgtcgtaattttaagtgtttggaactttctctgtcaga

SEQ ID NO: 22435 - DNA, 503 bp, Zea mays
  Coding DNA Sequence Number=SeqID_8032
tcactcttctcttcggaacttggaagacctaaacaatcataatggcattgtgtaataaggttggaaacatcttgaggcagggcgctgctcagagcagacaagcacctgttgcttccatgcttaattatattcgctgcatgtcttcaagcaagctttttgtcggaggcctttcatatggagttgatgaccagtctcttagggatgcctttgcaagctttggagatgtgactgaggcaagggttattactgatagagacactggaagatcaaggggatttggatttgtcaacttctccagtgatgactcagcaagttctgcacaatctgcaatggatggacaggatctaaatgggcgaaacattcgggtgtcctttgcaaatgatagacctgctggacctcgatctcctggcggcagaggttatggtggtgatggttttgcttctggtaggggtggtggttattgatccaatcttttaattccttgtttctttctgcgtatgttt

SEQ ID NO: 22436 - DNA, 572 bp, Zea mays
  misc_feature (403)..(403): n is a, c, g, or t
  misc_feature (406)..(406): n is a, c, g, or t
  misc_feature (478)..(479): n is a, c, g, or t
  misc_feature (544)..(546): n is a, c, g, or t
  Coding DNA Sequence Number=SeqID_8033
tcaccacataacaatggcgatggctttcaaaatggctactactgggatgtgggtaacggatgagtgcaagaactctttcatggagatgaagtggaagaaggtgcatagatacatagtgttcaagatcgatgaaaggtcaaggcttgtcaccgttgataaggtgggtggtcctggtgagagctatgatgatcttgcagcttccttgcctaacgatgattgtagatatgctgtcttcgactttgattttgtcacagttgataattgccgcaagagcaagatattcttcattgcatgggcaccaacagcatcaaggataagagcaaagatgctatacgcaacatcaaaagatgggctgagaagagctttggatggaataagctatgaagttcaagcaaccgatccnccngagatgggattcgatataattaaagacagagccaaatagatgccccctttttattaagcccttaattatgtnntagagctaatcaattaatccgtcaatcttactcttattattaataattattataatcaagtaacnnnaatccaatgactgtatgacatgtgct

SEQ ID NO: 22437 - DNA, 541 bp, Zea mays
  Coding DNA Sequence Number=SeqID_8034
taggctaccactctgaacaacatgtgtggtgatggcatggaggcatctgccagcgccacaggaggggtgaacaagcagccgaaaatcacacttttgaggatgtccctcacatgcatggccttcacttcactgcagcacggatgggcgcctgacgtctcacttctcacccgctacgtccaaacactgagaattcctcatgctcttacatcactcatgtggatctgtgaaactattgctgacttacttgtaccaacctgcgccaggctctatagagacaaatgtacttctaaaattgggagacggacgccattcatctttacaggatgaatcatcatctgcatatctgtaataataatcatgtgctccctcacacatgcgttaccctctcgctgacacagaccaaatactgcaatcgcctacacataagaagcagctgcactcggtcttgatcttcgcgatgtcattctggctgctggacttttccaacaacacggagcaaggaccctgactcgctctaatggaggacctcgcaagcattcac

SEQ ID NO: 22438 - DNA, 366 bp, Zea mays
  Coding DNA Sequence Number=SeqID_8035
ttcgggtcgcggaccaacctaagcaggtgtttgcatggaaaagggggacaaatgggtagggggggatatataggctacgttcccaacgatgctaccgggcccggccctgcaacgcagtcgtaggaggccatgaaggcggatgcatgcgctgggtgcgacaaacagaacatttgcgcctgcgcccacaaggtcccagagcccaatgtggttgctattgatgagaggttgactactgtgaaacacaaattattagttttgaatggaaagggaggtgttggaaagagcacattctcagcccaactctactttgcctgagctgaaatggaccatcaggttggcctttttgacatacatttatgtggccct

SEQ ID NO: 22439 - DNA, 367 bp, Zea mays
  Coding DNA Sequence Number=SeqID_8036
gcgtcacgagctcccgccgcaagagccgcaaggcgcactttacggccccgccctccccccgccgcgctctcatgtccgccgccctgcccacgcagctcccccaccagcaccccgcgcgctccatcccgatccccaaggacgaccagccgcacgccttgccccgccccctccaagccccccgcggcccacccgcgccgcacccctctccccgcccctgcctccttcccgcccccgtggaccccccccccccacccccccccccctcccccccccccccccaccaaccaccccccccgccaagaaaccctcctcaaacacaaccactccaccttccacacctcacatattcaaccatccccttaccctc

SEQ ID NO: 22440 - DNA, 196 bp, Zea mays
  Coding DNA Sequence Number=SeqID_8037
ccaccttcgcctcctccaccatctcctccgccaccttcacctcctccgccgtgtcctccacccccgtccccatcccctcctcctccttctcccccaccgccgtgtcctccacccccgtccccttcacctcctcctccttctcccccacagccgtctcctgcacctgcatccccatcacctgcacctgcttctcccc

SEQ ID NO: 22441 - DNA, 369 bp, Zea mays
  misc_feature (187)..(187): n is a, c, g, or t
  Coding DNA Sequence Number=SeqID_8038
acaaagcgtcgggtggaagatatttgccgggatatctaccgtgcagatcctgagtgggagatcattggacggaggtgcttcaatcctggtggggcgtatcctagggggtatcttggggaggacccacgaggaattcccaacaatcttatgcgctatgtgcagcaaggtgcgggtggtaggaggccanctctaacaggtttaggaaatgactatgcgacaagagagtggactggggtaattctgtggcgtatgatgtgcgtaattgtgtttttttggggtaccattcaaattgagtaatctgaggcgtttgaggctgggtattccaaataaaactgtgtggaattgtctgtgaaaatttaataatcgtgg

SEQ ID NO: 22442 - DNA, 220 bp, Zea mays
  misc_feature (29)..(29): n is a, c, g, or t
  misc_feature (58)..(58): n is a, c, g, or t
  misc_feature (67)..(67): n is a, c, g, or t
  misc_feature (100)..(100): n is a, c, g, or t
  misc_feature (116)..(116): n is a, c, g, or t
  misc_feature (119)..(119): n is a, c, g, or t
  misc_feature (143)..(143): n is a, c, g, or t
  Coding DNA Sequence Number=SeqID_8039
gtttaccgcccgatttgggctgctttccncaccccccgactcgctgacggcgcctcgnggtgcgacngggcccgggccggtcggggctctcaccctcccnggcggggggtgtgccngcnatctcgcgcccggcccgccgctgncgccgcctctcccgactccccttcccgcggcgaggccggccgcctctcacgctggcctggtcccggctcgctcgccg

SEQ ID NO: 22443 - DNA, 445 bp, Zea mays
  misc_feature (132)..(136): n is a, c, g, or t
  misc_feature (418)..(419): n is a, c, g, or t
  Coding DNA Sequence Number=SeqID_8040
ggatgtgatcttgattgccacccggaggatactaaggccaccaaagaaaggttctgctgttcagcgtccccgcagccgtacactcactgctgtgcatgaagcaatgcttgaggatactgtattacctgctgnnnnngttggaaagcgtgttaggtacagaattgatggatccaagatcatgaaggtgtttttggaccccaaggagaggaacaacactgagtacaagttggagacttttgctgcagtatacaggaaactttcaggcaaagatgttgtgtttgagtatcctattactgaggcttaggttctatttgtcagtttttaattttttcatgaattgcatatggtgaatgctggttaaaaattttgttaaaaagtttcctttaatgttggattttctttattgactttaaaaaannaattcttggcctcgtttatcaattta

SEQ ID NO: 22444 - DNA, 289 bp, Zea mays
  misc_feature (137)..(139): n is a, c, g, or t
  misc_feature (141)..(142): n is a, c, g, or t
  misc_feature (145)..(145): n is a, c, g, or t
  Coding DNA Sequence Number=SeqID_8041
tcctgagtttcagcagtcacagaaactccataaccgaaaatgcctttcaagaggtacgttgagattggtagggttgctttggtcagctatggtaaagagtatgggaggcttgtggtcactgttgatgttattgaccnnncnntanttcttgtcttttcccctgatatggtgaggtcccagatgaatttcaagaggctctcactcactgatattaaggttgatattattagggtccctaagaagaaggatctcattaaagccatggaggctgctgatgttaagaacaagt

SEQ ID NO: 22445 - DNA, 586 bp, Zea mays
  misc_feature (557)..(557): n is a, c, g, or t
  Coding DNA Sequence Number=SeqID_8042
ctaatccactgctgaggcttacattggtctcttcgccggcgacgagcacccagctctgtagaaatggctgatggtgaggacatccagcctcttgtgtgcgacaatggaactggaatggtcaaggctggttctgctggcgatgatgcaccaatggcggcttatcctagcattgttggccatcatcgccacactggtgacatggtagggatggtacaaaaggacgcacatgctggcgatgaggcacaatccaagagaggtattcttacgctcaagtaccctattgagcaaggtcttgagagcacctggaatgacatggacaaaatctggcatcatactttgtacaacgagcttcgtgttaccccaaaggagcaccctgttttgctgaccgaggctcctttgatccccaatgccatcagtgagaatatgacccaaattatgttggagactttcaatgctcctgccatgtatgttgcaatccaagcggcgctctcactctatgctagtgggcatactactgctatcgtactcgactctgatcatgagtgcagccacactgngcccatttacgaacgacatgcccttcctt

SEQ ID NO: 22446 - DNA, 407 bp, Zea mays
  Coding DNA Sequence Number=SeqID_8043
ggtttgtgtggctgcgccaaaagaagtcgcttaagcacacgttccgcccgattgggcgccaggttttgtacgcccccgaggtcaccgcctttgtggaggaccggcggattaggggcatgaccggggtcaaaaccaaggagctccttatttgggtcaccctttccgaaatgtttgtcgacagggacgacccctccaagatcaccttcaaaacgccccccgggcttggcaggacctaccccgtttccgcctttgccaaagaaggggccggttaagacggggcggcggccaagcccaaggattatgcccccgccccggcccccgccggtaaggctgctgccaaccaattaggtggcggcgtttggagcttttaccctgccggagtcgccaaacttgcctcctcaaaaaag

SEQ ID NO: 22447 - DNA, 556 bp, Zea mays
  Coding DNA Sequence Number=SeqID_8044
aagttcttcgcgaagctcgagacgctcgctgccagcttcctcgtccgaggcacctacacgacgcctcgtatcggccggtaccttgacctgctcaccgagctcaaggaaggacaggggctcgacgcgccttccttcgagctctccgcaggagagatcgcagagacgcggcacgcgatcaacggggacatctacaacatgcagaagaggcgcgcgcgttatgtcctcctgcgccttgacgagatgctgaccaccgatggcgccgtcgaatacaacgagccgctgatccagatcgagcatgtgctgccgcagacaccgactgtcgactactggctcgagcgattcgacgaggaagcccgcgagacgtggaccaaccgtctcggcaacctgctcctgctgaacggccgcaagaacgcgcaggtgaagaactacgacttcgacgtgagggcctcgaagtatttcaagggttccgcgatcttccagctcacctcacaagtgatccaggagaccgactggaacctcgacatcgtgaagcagcgacagcagaagctcaccgaga

SEQ ID NO: 22448 - DNA, 441 bp, Zea mays
  misc_feature (358)..(367): n is a, c, g, or t
  Coding DNA Sequence Number=SeqID_8045
tggaggtcgagcatccggccgccaaggttctcgtggagctggccgagctccaggaccgggaggttggagatgggactacctctgtcgtcatcattgctgcagagttgctcaagagagccaatgaacttgtgaggaataaaattcacccgacctctattattagtggctacaggcttgctatgcgtgaagcttgcaagtatgttgaggaaaagctgtctgtcaaggtggatagacttggaaaagactcccttattaactgtgctaaaactagcatgtcctcgaaactgattaccacggatggtaatttctttgcaaatctggttgtagaagcagttcaagctgtgaagactacaaactnnnnnnnnnnagtgaagtatccaatcaagagtattaatattttgaaagctcatggtaaaagtgccaaggaaagttacctgctga

SEQ ID NO: 22449 - DNA, 431 bp, Zea mays
  Coding DNA Sequence Number=SeqID_8046
tgctggtgctgcgtacgctatacagggggcgacctacgcgtcctgtttttttgggaccgttttcaagggtttcatatatgacattgtgagggttgggctggagtcactgcctgttgcagacaaggtgctcaacaaagatggacatcaagggcacagagaatggtttaccgaggttaactgcctggggcagttgaagcatccaaatatggtgaagttgatcggatattgctgcaaagatgaccatctgctccttgattacgagttcatgtttcgaggaagtgtcgaaaaccacttattacgaaagacagttactccattgccctggggtactaggatgtcaatcgcgcttggagccgtataagggcttgctttgctccacatcgctcagaggcccagcatctacagagatcacaagacattaaacattctgc

SEQ ID NO: 22450 - DNA, 558 bp, Zea mays
  Coding DNA Sequence Number=SeqID_8047
tccttaggtgctccatgtcttaatggtatgctttacctgattcatggactcgtacggagcggcggcctcacatgtgtcatattagtactactatttcggcgattcatgaatacaggtcctagagcaactccgacaggactgctctgcatgatgctgaccgacaagctcgcagctgacggcgctcgccttgctgctgaggaacaccgaggatctgatgatgagccaggcgatcaaatgagattcggcttccattgagtacctgaagacagtgagcgactgctgcactcggacgatgaagcttctagactattccatggcggccacgaccacgtacgagagttcggccggaattatgagcctcgtcccccggcacatggacgactacgtagtctacggcctcaacgcgtgcttgcagaacgtccgcatctgctgcgtgcgcctggacgccatagacaagctgcgggcgcactacgacgccctcgtcgacgccagtcgtcgaccctgacgccaactgataaggcctagccgaggaggcgtgcgattacaaagccatcatgt

SEQ ID NO: 22451 - DNA, 421 bp, Zea mays
  Coding DNA Sequence Number=SeqID_8048
gcgaccgcaagcaggagtagcccttgtaagtcgtcaggaaagcacgcgagaagtcgtcgcgctgctcttcgttgcctatatactccggctccgtcctccggggggctcggttggtaccactctaccactcgccagatctgcctgccttccctgctctccccgtcggctcaccgcgcgcaccatatctccccgtacacgaggggaccctatcatggaatcgcatccgtcctgcgctttgccggcggcgactgcagaagcgaccaaccatggcggcggcctgtgatgcttacaccgacaagaacgccgtcttccgtcggctgaaggccatgcccgagaacaagatgtgcttggactgcaacgcccagatccccacctgggcctccgtcactctacgggatctttctctggctagactgctgcg

SEQ ID NO: 22452 - DNA, 460 bp, Zea mays
  Coding DNA Sequence Number=SeqID_8049
ccagtttgtgggatggtgcccgactggcttcaaattcggaatcaaataccagcctcccagcgttgttcccggcggtgatctggccaaggttcagcgtgccgtgtgcatgatttccaactcccccagtgttgtggaggtttttttccgcattgaccccaagtttgacctcatgtacgccaagcgggcctttgtgccctggtacgtcggttagggtatggaggaaggcgagtttttccaggcttgtgaggatttggctgcgctcgaaaaagaattccaggaggtcggttctgagttttaccaaggttaggacggcgacaaaggtgttgagtactagacgctttaaaaaaaaagagttgtcgggcctttgtgcccctactatcctgtgatttgccctgagtggctcccatcgtgttatggttctgttgggttttatctatctgtcggtgtgtggtttccaacc

SEQ ID NO: 22453 - DNA, 588 bp, Zea mays
  Coding DNA Sequence Number=SeqID_8050
gaattgggaccactagactcacaccaggtggatcctagggcagaagacatccagatcggcgtgatcagagcacttgcactctctgttgcatcatatgctgccgttgtcctccgcaacaaagctctcatcacacacttggttttccattcgctacaacagtaacgatctggaatctgatggtgaccttctgcaccctccatgtggcacagattttactcttcttcgagcccgacgaaattgatgcacagacaaccatactctttgggttgctgaatggcacgtcaatggtgattgtcaatctgagcttaggatcctactccatcgaaatctaccagatgacaaaaatggagatcatacctttcactgagctattggagactatcttcctgaagaaaagattcagcgagagtatcaagctgtctcttctggtcttacttcgttgagaacgaattgcttcagctactgatctcaagataaatctggttgggtgcatcatttctgggctcgtcattgacaccacctgtgttggtcatattcgcacaattacgatacataagaggctgtagggatcctcaacgcaacttctgt

SEQ ID NO: 22454 - DNA, 589 bp, Zea mays
  Coding DNA Sequence Number=SeqID_8051
gacgaataagacagtcgcggccaacaacgctgttctactcttcgagacgtcgagtcatcgagcgctacattgaggaccatggcaagagtcccgtcactaatgaggacctcaccatggatgatatccagccggacgagaccaacaagatcgagaatcccaggcctttgcaggctgcaagcattccaggactccttgcgatttttcaaaacgagtgggatgctctcatggtttctaattttgctttggagcaccagcttcacacagtgagactagaacttagtcatgcactctaccagcatgacgctgcctgccgcgctatagccagattatagaaggaaagagatgacgctagagcacttttggctcaaactgagagacagattcctgcgtcagttgcaggagctgctcctgcagctgttgtttccaatggaaaaagagtaattgaagatgaaattggccctgatgggaagaagattcgtcctggtatcaaccccgtcatgattgatgaacttacaaagtgttatgccatgctttccgcccgtgtaagaaaagactggttcctccaactctgggtacgatggatgcactc

SEQ ID NO: 22455 - DNA, 474 bp, Zea mays
  misc_feature (90)..(94): n is a, c, g, or t
  misc_feature (96)..(97): n is a, c, g, or t
  misc_feature (445)..(445): n is a, c, g, or t
  Coding DNA Sequence Number=SeqID_8052
gatgcgaaccagaagatagattacgtgttcaaggtggtgctgatcggtgactctgcggttgggaagtcacagatactagcgaggtttgcnnnnntnncgagttcagcttggactcaaagtccaccatcggagttgaatttcaaacacagactttggtcatcgatcataagaccgttaaggctcagatctgggatactgcaggccaagaacgatacagagcagttacaagtgcatactacaggggtgctgttggggcaatgttggtttatgacattactaaacgtcaaacctttgatcatataccccgttggctagaagaactgcgtaaccatgctgacaagaacatagtcatcattctcataggaaacaaatgtgatcttgagagccagcgtgatgtacccactgaagatgcaaaagaatttgctgagaaagaaggcttattttncttagagacctcagcattggaagcaacta

SEQ ID NO: 22456 - DNA, 556 bp, Zea mays
  Coding DNA Sequence Number=SeqID_8053
gaaccagtgggcacactttaactgtgaaggtggttaatactaagatggtcatgcaaaaaggccgtcctgatggtcctcaaccccgtcaaatgcggattgctgaatgtttggttggtgatgagactggagtgatcatattcactgcaagaaacgatcaagtggatttgatgaaagagggtaccactgtcatcctgcgtaatgccaaaattgacatgttcaaaggatcaatgagacttgctgtggacaagtggggccgtgttgaagtcatagaacctgcaagtttcactgttaaggaagataataacttgtccctgattgagtatgaactggtgaatgttgttgtggaatgacttgttgggacattctgaaatctgtgctgtgttctaatgatgaataaaaacaaattcagcaaagaaatctaattttgtctatgggacatgtaatcatgcttatcttaattcaccttactaggaatagagatctgtgaagccagtagtaccagcagctgcttcttactgctgcatttgacttgatggatcttgtagcttcaacaact

SEQ ID NO: 22457 - DNA, 409 bp, Zea mays
  Coding DNA Sequence Number=SeqID_8054
agatcattcttatcagtcgctacgccgggcaggtcgatgtgcgccgcgtgacgctggtacagctgctggtggcctcggcctgcgccttcgtgctgatgctgcccaacggcgaatctttacccacgctatcggcgccgctgctgttcagcgcgctgggccttggcgcggccagcgcgctgattcaggtcaccatgaactgggcgcagcgcagagtctcgccgacgcgcgccacagtgatttatgccggcgagccggtgtgggccggtgtggtcggacgcattgccggcgaacggttaccggccgcggcgctgctgggcggcgcactgattgtctgcggggtgattgtcagtgaactgcgcctgcggcgcaaaaaagcggctcccggagcaggcaccgcagaagccttaag

SEQ ID NO: 22458 - DNA, 507 bp, Zea mays
  Coding DNA Sequence Number=SeqID_8055
gaccaagtatcctgaatctgacatttactggaagaaattcgaagagaaatatcacttctcatgccaatttacagctgatctctttgctatgaaccacacagattttatcatcaccagtaccttccaagagattgctggaagcaaggatactgttggacaatatgagagtcacactgccttcacccttcccggactctaccgtgtcgtacacggtatcgatgtcttcgatccaaagttcaacattgtctctccaggagctgatcaaaccatttacttcccatacactgaaaccagccgtaggttgacatcattccaccccgaaatcgaagagcttctttacagctccgttgagaatgaagaacacatttgtgtattgaaggaccggaacaagccaattatcttcaccatggcaaggttggaccgtgtgaagaacatcaccggacttgtcgagtggtatggcaagaacgcgaagctcagggagttggtgaaccttgttgttgttgccgg

SEQ ID NO: 22459 - DNA, 542 bp, Zea mays
  Coding DNA Sequence Number=SeqID_8056
gcgacaatggcgacccagatgagcaaaaagagaaaatttgttgctgatggtgttttcttcgctgaactgaatgaggttctgacaagagagcttgctgaagatgggtattctggtgtggaagttagggttacaccgatgcgcactgagatcatcatcagagccactcgaacccaagctgttcttggtgagaagggaaggagaattagggagcttacctcagtggtacagaagaggttcaagtttcctgagaacagtgttgagctttatgctgagaaggtcaacaacaggggtctttgtgctattgcccaggctgaatctctccgctacaagctccttggtggtcttgctgttaggagggcctgctatggtgttttgagatttgtcatggaaagtggtgccaagggatgtgaggtcattgttagtggaaaattgagagcccaaagagccaaatccatgaagttcaaggatgggtacatgatttcttctgggcaaccagtcaaggattatattgactctgcagtgagacatgtgctcctcagaca

SEQ ID NO: 22460 - DNA, 358 bp, Zea mays
  Coding DNA Sequence Number=SeqID_8057
caggacggcggagaaaattgcggaggcggcgaggcaggccctcccggcgctggaaaccctggagcaggcgttcagggagtgctccaaggggaaggccttttttggaggggacagcgtggggcttgttgacgtcgtgctcggcggccttgttgggtggctgtacccccccgaggccattttcggggtgaaggccctttaccccggcaggaccccccttctggcggggtggggggaacggttttgccccctggagggtgtcaaagggctgatcccccccgtggacaggcttttggagtataccaaggccaggcgggccgtatttggccttcccccgctccgtccttagggaaagtggaca

SEQ ID NO: 22461 - DNA, 406 bp, Zea mays
  Coding DNA Sequence Number=SeqID_8058
gatgggttcgaatctggagtctcttcagaagcttctcctcactaaagccgtcttcgtcgacgacgacaccttctccaaagcctctctcgccgctgatcaagcccgcaccatcaagcttctcgagcaacgagtccacaccttagaaagagaggtcgatgccgccatcaccgccgccgctcgcgctcgttccgaaaaacgacaagccgaggcagcacagaaagccgctgaatcacgcgctcaagagatcaccaaggagctcgaaaacaccacaaaggtgtttgagttgcacatggaagaactgcgtgctaagcaagaagaatcacgaagcgtgataacgacattaaacttctggaagctattattcaaacacttggaggaaaagaatcgcttcctaaatctatgtaaa

SEQ ID NO: 22462 - DNA, 469 bp, Zea mays
  misc_feature (163)..(165): n is a, c, g, or t
  misc_feature (404)..(405): n is a, c, g, or t
  misc_feature (440)..(444): n is a, c, g, or t
  Coding DNA Sequence Number=SeqID_8059
agttgctgtgattgtctgtaggatcagaagaagcggagttaaaatttttttccttgcggagatttatgctctactaggcgttcccctttcatatgtgctttggtacaggcctctctatcgtgctatgaggacggatagtgcactgaagtttggttaggttttnnntgttctacttgctgcatatagcattttgcatctttgctgcaattgcacctccagttgtttttcatggaaaatcattaacaggaatccttgcagccattgatgtcttctcagaccatgtattgagtgggatattctatttggttggatttggcctgttttgctaggagtctcttctaagcttttgggtgcttcagaaaatatacatgtatttccgggggcataagcgagactgttctcannattttgatccattggcttttataatgtcagtcacnnnnntgcgtggcatggtatattctttatt

SEQ ID NO: 22463 - DNA, 557 bp, Zea mays
  Coding DNA Sequence Number=SeqID_8060
acagttgactgccaaacccaggcttcttgagcctgtttacctggtggaaatccaggctcctgagcaagctcttggtggtatctacagtgttctgaaccagaaacgtggacatgtctttgaggaaatgcagaggcctggtaccccactttacaacatcaaagcatacctccctgtcattgagtcctttggattctccagcacattgagggctgcaacatcagggcaggctttcccacagtgcgtctttgatcactgggatatgatgtcttcagatccaatggaggctggatcccaagctgcaactcttgttactgacattcgcaagaggaagggtctgaaggagcagatgactccactctctgagtttgaagacaagctttaaattttttaaactgcttttattatgaacttatctaagtgataaaaacttggttaccgtaggttttaaagtccagtatcttgagttttgtttgtggttttatcagtgagttgttgtacttcgtattatttgtcgttgcatcgatgtatttttggtccataggattttgcatcgatgc

SEQ ID NO: 22464 - DNA, 580 bp, Zea mays
  misc_feature (152)..(153): n is a, c, g, or t
  misc_feature (201)..(204): n is a, c, g, or t
  misc_feature (290)..(291): n is a, c, g, or t
  misc_feature (471)..(471): n is a, c, g, or t
  misc_feature (530)..(532): n is a, c, g, or t
  Coding DNA Sequence Number=SeqID_8061
tcccatcgattccatttcttactatttttcgtcttccttgattccaaagtcatcaataaagatcgcgattgtggtgttagggtttcttttcgtttgtttaatttgttgtgtgcgatgaagatcgaggaattggaggatgcagagggtaattnngatgaagaagagaattacgagaggcaaattgtgagggttgatgctaannnngcgttggtgggagcaggtgcacggatcctgttttatcctacacttttgtataatgtgcttcgtaacaagattgaaactgagttcanntggtgggatcaaattgacgagtttttattactaggcgcagttccattccccaaggatgttcctcacttgaagaaccttggtgtcggcggtgtaattaccctgaatgaaccttatgaaactttggtgccatcatcattgtatcatgctcatggaattgatcatttggtaattccaacaagngattatctatttgccccctcatttggggatatcagccgagccgtgcagttcattcatcnnnatgcaacttgcggtaaaaccacttatgttcactgtaaagctgggcggg

SEQ ID NO: 22465 - DNA, 545 bp, Zea mays
  Coding DNA Sequence Number=SeqID_8062
agcggcataagctcgaggagcataacaccgaggcagatgaacttgtggtggaggatgaggaggtggatcatgaggaccatgacgatgatgacgagggtgatgatgaactccatggggatgtcagtggaagtcaaagcaatagcaggagtgacaagaagagccgcaaggccatgctgatgcttggcatgaagcccatcactggtgtcagacgcgtctctgcaaagaaaagcaagaatatactctttgtcatctccatgccggatgtgttcctgatgccgaattccgactcgtatgtgatattcggcgaggctaagatcgaggacctcctctcgccgctgcagacccaggcagcagagcagttcaaggctcctgacttgagccagatgatctctaatccttagacttctggtgcggtacaggatgactatgatgtggaggtcgacgaaactgctgttgaggccaagggcattgagctggtgatgagccaggcatctgtttctaggtccgaggatgtcgaggtcctctaggcgtctaatgtggacatt

SEQ ID NO: 22466 - DNA, 409 bp, Zea mays
  misc_feature (332)..(332): n is a, c, g, or t
  Coding DNA Sequence Number=SeqID_8063
gcatggacccaacatctgaagcgaacgagcttggtctactaagtctgaagaatgatctgaaaaggcatgactggtgacatgttcatggattgctttatcggtctgatatagaatacagataagctatagaacgttactcacacgcattgaggatcgatccagataacatataaattcttccagacttgacccttctccaggcacagaagaagcacttgactggctactctgagactaagcaacaacttttgatcctatagtcacatcaccgcatgaactggattggtattgcagatgcccatcattcgaattcaaatccttccaatgaccancaagcttggcggctgccaaggaacaccctggagaaggttttccccccaaaaaggagcgtttttgacccctggacctg

SEQ ID NO: 22467 - DNA, 455 bp, Zea mays
  misc_feature (92)..(93): n is a, c, g, or t
  misc_feature (114)..(116): n is a, c, g, or t
  Coding DNA Sequence Number=SeqID_8064
ttttttccaggatctcttgccactgctccagcacctcgttggaaaaactcctcaatcctcagaaaaagcatccttctttcaacaatccatgnngggattcaagttagtggaggnnncgagtcagaactgtgtcgagacgagtcagccgcgttcgttctcaagttcgttgccatggcatcaattctcttggcgggcatggccggaatcgccatccctctcgtcggaaaacatcgccggttcctccgtaccgacgggaacgtcttcgtggcagcgaaagctttcgcggcgggggtgattcttgccaccggtttcgtacacatgctctccgatgcatcagaggcgctcgaaagtccttgcttgccggcattcccgtggcacaagttcccgttcgttgggttcttcgctatgatggcggcgcttttcactctcctccttgacttcgtcggaactcagta

SEQ ID NO: 22468 - DNA, 575 bp, Zea mays
  misc_feature (281)..(282): n is a, c, g, or t
  misc_feature (332)..(333): n is a, c, g, or t
  misc_feature (466)..(467): n is a, c, g, or t
  misc_feature (479)..(482): n is a, c, g, or t
  misc_feature (534)..(536): n is a, c, g, or t
  misc_feature (547)..(547): n is a, c, g, or t
  Coding DNA Sequence Number=SeqID_8065
ggcgattgttgataactgttccgaaagggctattgagataaacgatggcaactatgacggcatcttatgtggtgtcaagaagcgcgtgcctcaaccaccatggaaatatgagaacagaggccaaagggaatttgcctcagataactctcaatacccaggcattgacctatgttgggttgagatctctgaacaagttgcacgtgcgaacggcacgtgcacgtgctaccaaaacctcttcttcatcgatggcaagtgataaaactggggggagtgagaagaannttttggggaagatattgtgtgggatgaacgtggtgtttgtgggagctganntaggaccttggagtaaaactggtggacttggtgatgttcttggaggacttccacctgctttggccgcaaatgggcatcgtgttatgtcagtttcaccgcgttacgaccaatacaaggatgcatgggacactannatgctggtcgannnnaaagttggagataaaatagaaactgttcgtttctttcactgctacaagcgannngttgatcgtgnttttgtggatcacccaattttccttgag

SEQ ID NO: 22469 - DNA, 500 bp, Zea mays
  Coding DNA Sequence Number=SeqID_8066
gtttcaaatgttgtcagtgctgacgaatttgagtacaaagatcctgtggatggttccatttcatcacatcagggcatccgatatttgtttgaggatggatcactattggttttccgcctctctggaactggatcagaaggtgcaactattcgactatacattgagcaatatgagaaggatccatcaaagactgggagactttcacatgaagcacttgctcctcttgtggaagttgcattgaaacttcccaagatgcaggaatttaccggtcgatccgctccaacagtcattacataaatgcgtgctattggagatcggttagacctaaagcttcaccaagtcatttcttcttgtcagtccacatttcaatccagtgttagtcttatgagtagccaacctgtattgttggttgtttgcagcccttgctatgggcacatgagtggattttaaattacttttaactaaattttgatgtgctgaataattcgaaactgccgagt

SEQ ID NO: 22470 - DNA, 510 bp, Zea mays
  Coding DNA Sequence Number=SeqID_8067
agtgccattatcacgcagttcctcccgccagttacttcaatgggcttcgaacatccatccgtgcaagcttataggctacaactagcgcttgcggcgagcgccttacaacagtcaattgctcaattgcaacatcaatccttggcacatctaaccatacaacccatagcaacgcaacaacaacaacattgtctgccatctctgagccacttagcagtggtgacacttgtcgcctacttgcaacagcacgtgcgtgcatccaagtcacctgttttggcgaccgtagctgcaagccagcagcaacaacagctgcaacagtatatgccagcgttcagtgaattagccatggatgagacctgcagtcttcttcgagcagctttcatctagagcagctctctgtgggcaatgcagcatacagtacgtacaacaacagatgtctgcaacagatctgtacaagctaaaactcatcagttagttatggcaaagagatagggcttgctagccacagttgct

SEQ ID NO: 22471 - DNA, 472 bp, Zea mays
  Coding DNA Sequence Number=SeqID_8068
agcccggtgcgcacgctgttgaacgcgctcgacgcggtgctggagaacgaatcgctgcatcgggagtggatcgatgccgacgttgacgtcagtttcgcggcgccgcgatggcgcaagctcgtgcggcgctcccacggcgaaggttcaccgaccaatcgccgctatctcgaactctgcgtgctgtcgtacatggcagaggaactgcgtgtcggcgatctgtgcgtgtccggctccgacgcgtacgcggactatcgcgacaacctgctgccgtgggggcaatgcgagcagcaactggtggaatactgcgagaagctcggcatcccaacgaccggccccgaatttgtccgtcatctccggaaatggttggcggacgccgccagcaagctagacgaggaattgccctgcaagcgcgagcatgtcgtgatcgatcgcaacggtgaaccgatcctgcgcaagaccgtcgcgaaggaga

SEQ ID NO: 22472 - DNA, 438 bp, Zea mays
  Coding DNA Sequence Number=SeqID_8069
gacacgaggtgttaccatgaggcgcgagaggtacagaagaagatgccacagcgatacattttttctttttagtgagagcagtgtcctgctggcatgttcaggaaccaccgcatggggactggaagccagcagaactctctgctcacaacaagagaggaaagcactgctatgaagacgattgactttggtcgcgcacagtctattacaccaaacgaaaggctcaatgatactgccggaagggcttattatggtgctccagaggatctacacagatcatacaggatggaagcacacattcggaggataggtgttataacatacattctgctctgaggcagaagaacattctgggcaaggacagaatctgggatcttgcgggccgtattgagggctgatcccaatactgacgatgcaccatgggcttcactatcgggtgag

SEQ ID NO: 22473 - DNA, 589 bp, Zea mays
  misc_feature (119)..(121): n is a, c, g, or t
  misc_feature (357)..(358): n is a, c, g, or t
  misc_feature (438)..(439): n is a, c, g, or t
  misc_feature (444)..(444): n is a, c, g, or t
  misc_feature (465)..(466): n is a, c, g, or t
  misc_feature (506)..(507): n is a, c, g, or t
  misc_feature (517)..(518): n is a, c, g, or t
  misc_feature (538)..(539): n is a, c, g, or t
  misc_feature (550)..(550): n is a, c, g, or t
  misc_feature (552)..(553): n is a, c, g, or t
  Coding DNA Sequence Number=SeqID_8070
cctgcaaggtgttatcgtcaaattaaaaacaagccataccccaagtcacggttttgccgtggtgttcctgatcccaagatcagaatttatgatgttggtatgaaaaagaaaggtgttgnnnagtttcctctctgtgtccatctggttagttgggagaaggaaaatgtttcaagtgaggcactggaagctgctaggattgcttgcaacaaatatatgtcaaaattcgctggaaaggatgcattccacttgagagtcagggtacatccattccatgttcttaggatcaacaagatgctttcatgtgctggagctgataggctccagactggaatgagaggagcatttggaaagccgcanngtacatgtgctagagtggctattgggcaggtcctcctttcagttcgctgcaaggacagcaacagccatcatgcacaggannccctncgtcgtgccaagtttaagttnnctggtcgtcaaaagatcattgttagcaggaagtggggatnnaccaagtttnnccgtactgattatctgaagnncaagtcacaanannagattatgcctgatggagtacatgcaaagcttcttg

SEQ ID NO: 22474 - DNA, 399 bp, Zea mays
  misc_feature (309)..(310): n is a, c, g, or t
  misc_feature (358)..(358): n is a, c, g, or t
  misc_feature (360)..(360): n is a, c, g, or t
  misc_feature (363)..(364): n is a, c, g, or t
  Coding DNA Sequence Number=SeqID_8071
ttttctctctcctcacttccatattttctttctttttctccccccccactccctcctccctctctccccccccccttcctcctcctccccctcccaccccctccctcctctccttcttccccctccccccccccccctcctcccctccccctcccccccccccctcccctcccccctccccccccctctccccccctccccccctccctctccctccccacccccccccccctcccccccttctctctccccccccccccccaatccccctccccccccctcttttttcccgcacgcaaacaaataatnnccccccccccccccccccctccctcctcccccccccctcctccccctntnctnnccccccccccctcttcttttttgcgcaatattttt

SEQ ID NO: 22475 - DNA, 499 bp, Zea mays
  misc_feature (285)..(286): n is a, c, g, or t
  misc_feature (348)..(349): n is a, c, g, or t
  misc_feature (416)..(418): n is a, c, g, or t
  misc_feature (443)..(444): n is a, c, g, or t
  Coding DNA Sequence Number=SeqID_8072
taaagttttccaattccattcctctctagcaagaaagaatggctaaagatgttgaggttgcagaacacggtgaatactcagctaaggactaccatgacccacctccagcaccattgattgacccaaaagagcttacaaagtggtctttgtacagagctgtgatagcagagttcatagcaacccttctcttcctttacatcactgtgttgaccattattggttacaaaagacagagtgatacttccattacaggtaacactgagtgtgatggagttggtattttanncatagcttgggcctttggtggcatgatcttcatacttgtttactgcactgccggtatctcannaggacacataaaccctgctgtgacatttgggctgttagtgggacgcaaggtgtcacttgtaagggcnnnactttacatgatagcacagtgcttnngtgcaatctgcggtgctggacttgccaaggggttccaaacttcatactacaacag

SEQ ID NO: 22476 - DNA, 551 bp, Zea mays
  misc_feature (77)..(79): n is a, c, g, or t
  misc_feature (94)..(95): n is a, c, g, or t
  misc_feature (239)..(240): n is a, c, g, or t
  misc_feature (321)..(321): n is a, c, g, or t
  misc_feature (448)..(449): n is a, c, g, or t
  misc_feature (453)..(456): n is a, c, g, or t
  misc_feature (517)..(518): n is a, c, g, or t
  Coding DNA Sequence Number=SeqID_8073
tactccattagcgacagttgacccataaatccacgaccttattgagaaggagaagcgtcgccaatgccgaggaatcnnnctcatagcatcggannaacttcacatcgttcgcggtgatagaagctctcggaagcgccctcaccaacaagtactcagagggcatgcccggaaaccgttactacggtggcaacgaattcatcgaccagatcgaaaacctgtgtcgctcacgcgcccttganncctttcacttggaccccaccaagtggggtgttaacgttcaaccttattccggttctccggccaacttcgccgcctacacgncggtgcttcagccacatgaccgcatcatgggtctggatctgccctccggtggccacctcacacatgggtactacacctctggtgggaagaagatctctgccacctcaatctactttgagagtttgcnntatnnnntgaattcaagcactgggtacattgattatgataggttggaggagaaagccttggattttannccaaggttgatcatttgtggtggcagtgcttat

SEQ ID NO: 22477 - DNA, 355 bp, Zea mays
  Coding DNA Sequence Number=SeqID_8074
tgcacgccacatacctacgtaactgcgtacaataactagttgctgaggtcaataaggcgtctcccaacaaggacctcctcaactaccactataacctctttgagattgctcgcacctactagaagaacagcgcgtcgtgcctgaccatactgaccgacaagaagcacttccagctgagctttgagaacctatagaccgcgcgcagctccggtgtaaactgccctctgctctgcaaggagttcgtcatcaacgcctggcagatctactacgcgcgctcgaaaggcgcggacgcggtcctcctgatcgcggccgtgctgccggacatcgacatcacctactttcttcgcgtctgcaa

SEQ ID NO: 22478 - DNA, 564 bp, Zea mays
  Coding DNA Sequence Number=SeqID_8075
taaaaaatgtcgatgcctggctaatcaacgtgcagagcctgcgccagggattgtcgcaggagctggggcgggtagcgctgtttctgttgggcatgtggctgctgttcgtgctgttactggtgctggcgcatcaggtgattttccgcctggtacggcggctggaggatctctcggcgcgactggcctggcgcgctaattatgacggcctgacgcgcctgcttaatcgcagcgcctttttcgaccagtttatcgcgctggcgcggcgctgcgaacagcagcaacagccgctggcggtgatccagctcgatatcgatcatttcaaaaaggtcaatgatagctggggccatcacgcgggcgatcaggcgctgatgcgcgtggccggcgtcatcaaacatacgctgcgcccttacgacgtggccggacgcatcggcggcgaggagttttgtatcgtgctgccgcacaccacgctggctgaggcgcagggcgtgtcggagcgtatccgcagccggctggcggccaaaaccattctggtcaacgccagcaccacctttagcgttacgttgt

SEQ ID NO: 22479 - DNA, 563 bp, Zea mays
  Coding DNA Sequence Number=SeqID_8076
ggaccatttcccacggttgtcggcgggtaccagtacctcttcgtcgccatcgacaagttcaccaagtggccagaggccacccctgtagtcagcagcacccagggtgccgctgtcaccttcctcaaatccatcgtctgtagatgtcggatcttccaggagtattgcgagggcatcggtacccagctctgcttcgcgtacgtggcttatcccaggagcaacggtcaagtggaaagggcaaatgcacagatcttcataggactcaagacatgcacctatgactgcttgaagaagcatggagcaaattgggtcagtgagcttccgtccgtgctatgggggaaccggacaacacccagccgagctaccggggagaccccgtactccctggtgtacagggctgaagcctgccttcccccggaaatccttttggactccccacgggtccaatcttttgatggatctatgcaggaactgctacagcgcgaggacgtggaccctatcaacgaacgcagatggcaggcggcgaccagaaatgcacatggcagccaggcgctcaggcgttacca

SEQ ID NO: 22480 - DNA, 351 bp, Zea mays
  Coding DNA Sequence Number=SeqID_8077
ttcaccttcatcacatatacatctcattccacttcatcatactctccatctatacacaattcatcatacacgccatctatacacaccgctccttgtaactgtggaagtccgcttttgcggcattccacgttttcacacttttacactttttcgcacttaaagtcattacaccctcattctggtggatattactcatgtcgtacatcaagaatttcggttgttgtgacttccgcatcttgcattgttgatacaggcacttgcatcattggaggaagccctccaagtagtatcattgacacaggctctcatggaactcgtttcatttgtatctcttttccttcaatctctgga

SEQ ID NO: 22481 - DNA, 586 bp, Zea mays
  Coding DNA Sequence Number=SeqID_8078
gcgagtgacatctagtgttccaaactccttcgagtgagtacaggccaaggtacagtgcgacatggattgatcaccaacaggcggacaagaacgaagaggtccccgagcttgctccttttgacccaaccatcaacaggaataaaaacagtgtgttaataccatagtcatcagatgacgtggatatacttgtgagagaagacagacagcttgactggaaacgagtctatagagccaagctttgcggcgtgaaaaaaaagaagaagaaacatgtgggacttgattcttctcttatggagatcggagacgattatgtcacaggtgacgatcgagttatagaggatggtgaaggagaagggattgtgctcgctggtgccgctgccaccagatacccttgggaaggaactgacttagactataagtatgaagatctgcttgactgagtattcgacattttgcgtgagaacaacccagatcttgatggtgatagaagaacaactgttatgacgccccctctagtactcccggtgatagaacaaagaagacagcttttgtgaacttcatggcacttgtgccaaacactgcatag

SEQ ID NO: 22482 - DNA, 559 bp, Zea mays
  Coding DNA Sequence Number=SeqID_8079
atgcgagcggcagctatggatccataacaccaacgacccgagtaatgaaagataatgcggcttctggaccataaaatccagcgccgccgtgtggaagaactactatggcgtctacgtcttaaagggagggctcatcatgcttgaggattatcatctagtgctagatctagctgagatccacatacaatggatgccttgaagcgttgagtatgagtgccgaaactgcgcctacgcattcttttacgtcgctcatgatgtctatcacattaaatgcgctgactctctccgcgcgcgtgggcgcaagacatctggtattgggcgtttctctacagctgagcatgacagaggaggcgctgagacctttggtgatccacgggcgtttgctgtcaagttctacacaagagagggtgactttcgatatcgcgtgtaacaacatgcctgtgtttttcatacgagatgtgatgaaattccctgacatgctgcacgctttcaagccgaatccaaagaccaatttgtaggagaactggagaatagtagatttcttctcttcacatccaga

SEQ ID NO: 22483 - DNA, 550 bp, Zea mays
  Coding DNA Sequence Number=SeqID_8080
ggcaagctaactgtgtgactcagaccacttcagcttcttgagtacagtgggtttgaagatggtcagatctgctggctttaaactgtgacgggtcacataaccgtgaagacaaaaattaaaactataagaaaaaggaaaaaaaaaaaaaaagggggggccgtttaaaaatgtcctggggggggccaaaattaaccctgccccatttttttggaaaaagggggcccttttagggggagttttaaaaatttgggccgggcctcttttttaaaagccttggacacgggaaaaaagatgagaaaattaaaggcttcatatgggatctcattactccaactgaagacgggcagacacgagagttacagaatcatctaggcctgtcatccccggtaccgagaggtagaaaagggaagaaagtaaagactcaaacaagctcatttgatatacaaaaagcagaatggcttcgaaaatacaatcctgagcaactacttcaagatgaatgctacaaaaaacatataaaacaccactgtaataaagttttgcttcgtgtaag

SEQ ID NO: 22484 - DNA, 287 bp, Zea mays
  Coding DNA Sequence Number=SeqID_8081
atccacaactagaccctcaacagcgctggacgtcgatcttataggatttttcctctttctcgctctgaccatatacacagcaacacgagctccaaatgcaatagatatccggagcttgcagcatttgccagatcgcactgagaaacgctcgatattcataagattcaagcagagcttgtgtcatgtcttccgaccgtacctcacttttctcatctacaaaagctgcaggatgagctgcatacctcttggaattctatggagggacatccatctctgtcccggtggca

SEQ ID NO: 22485 - DNA, 133 bp, Zea mays
  misc_feature (33)..(33): n is a, c, g, or t
  misc_feature (42)..(42): n is a, c, g, or t
  misc_feature (45)..(45): n is a, c, g, or t
  misc_feature (60)..(60): n is a, c, g, or t
  misc_feature (71)..(71): n is a, c, g, or t
  misc_feature (86)..(86): n is a, c, g, or t
  misc_feature (94)..(95): n is a, c, g, or t
  misc_feature (98)..(98): n is a, c, g, or t
  misc_feature (103)..(104): n is a, c, g, or t
  misc_feature (107)..(107): n is a, c, g, or t
  Coding DNA Sequence Number=SeqID_8082
tgtgatgtgtgtcgttatttgctcttgtgttgntgagtgtgntgntgtgtgtgtgtgtgntggtgtgttgntgatgatcgtgttgntgatgtgnntgntgcgnntgnatgttggtgtgtgtctgtgtgatatg

SEQ ID NO: 22486 - DNA, 415 bp, Zea mays
  Coding DNA Sequence Number=SeqID_8083
tgcccgtgctcgttccaaagggaaaaactccgacgaagaagcccccaaggccgcccagaagaagttaaaacttgtgcgcacaagccctgagtatgggatgccctcagtgacctttggcagtgtccacccctctgatgtgttggatatgcctgtggatcccaacgaacccacctattgcctttgtcaccaggtctcctacggggagatgattggctgtgacaaccctgacgtaagaaccggtttgcctcagggcggggggctctgggggacaggaagggagttgggtaccagaagggggtaagggccgaagagtgggacctcaggacaggaggaagggagttggaggtggttggccttggacccttcaagaatcctcccacaggatggaataagggaatgctcctgaggactctca

SEQ ID NO: 22487 - DNA, 497 bp, Zea mays
  misc_feature (173)..(173): n is a, c, g, or t
  Coding DNA Sequence Number=SeqID_8084
acgcgggcgttgcaatacccatgatgacacacagaagatcggggagaagtattccaactccaacattgaaattcatactttcaatcagagccagtatcctcgcattgggaccgaggacttcttgccacttccaagcaaagggaaatctgggaaggaggggggggatcctccangccatggggatgtgtgcccctctttgagtaacaggggaaaactcgacatcttattgggtcaggggaagggaggtgtcttcgttgctaactcagacaactggggggcgataggcgacatcagtatccaaataggacgatcagatttgcgtaatttctttcctgtgttaatacttttcctgtgtgctttgaattgaaaattgtgtccttaatcaggacagagatcctgagaccatctgatcaataaccagaatgagtactgcgtgggggtgactccaaaaacattgggtgaggtgaaagggcgggctctcatctcttacggaggag

SEQ ID NO: 22488 - DNA, 100 bp, Zea mays
  Coding DNA Sequence Number=SeqID_8085
agcaacaaacatctactccattcagccagatagtttgtgcttactttcagcagcaacaattttttccatttaaccaattcgccgcattgaaccccctttg

SEQ ID NO: 22489 - DNA, 101 bp, Zea mays
  Coding DNA Sequence Number=SeqID_8086
agagctgtcagcactcccgcggtcatgtctaatatgtgctagctgtgtgccttgccaatgaataagctgctgctctctcttttgcatagtttacatctacc

SEQ ID NO: 22490 - DNA, 492 bp, Zea mays
  Coding DNA Sequence Number=SeqID_8087
gcgccgcgttgtttgagatgctgacgcccgtgattgacgtcatcatgaagaacatgaagcctgtttccgacattcctatcctaggaaaggatgtcgccatctgcacgaatccaagtgatctgagtcttgccatgggaagcctgtcgattgtggcacttgtggtaactgccatcgtaaggcatgttgccatcttctttccatactcgaccaagtcagttcctcgtggagcgctgtttcaaagaaccagcttgacagtgttctttgttgttgctgagcttgtctcaaccctgtatcttgcaatgtcgctgctggcaactatcaccgaggaacttcaacgtatcaagaacatccaccacgacatgcactaccaatgtcctactgccaataccgacctgtacggctgcgccgctatcctcacccttgacgctgctctcatgtgacttggttgccagatgctgcccctcaatgcaaatgctgactacccttgacgag

SEQ ID NO: 22491 - DNA, 547 bp, Zea mays
  Coding DNA Sequence Number=SeqID_8088
aattatcccaggaattacctcttcttyaggaattgcagcagaactaggcattccgctaacccatcgaggtgttgcyaccagtttcagatttttwtyttgacactccagaaatkgtgggacadawccactatatgtagcyggaaawgcagccgahcctbacactacyttggttgtgtacatgggtktgtcaacacttccatcactggcaccaaagttaatgaagcacggkctgccaccagaaaccccttctgttgcagtagarcccgggactacacctcaacaacgaatggkgttcgcgttgttaaaggatcttgttgattaggtcaagtcagccgatcttgtttctccaactctaataattatcgggaaarttgtawccttktcaccattttgggttgagtyatcttaacatgatgcccttaaaattgagawctcgtattcaakttaagccagaagataatacgttttyatgattttagtgatcggacaatacatacttkagtatkcaatatcccagatatkagcagttcgagttggggtcatttat

SEQ ID NO: 22492 - DNA, 510 bp, Zea mays
  Coding DNA Sequence Number=SeqID_8089
gagctcttcgtttaccctgcgctgtcacccaccacgcaatactcgctacgagcgctgctggtatgggccgatatcgcgcctgcgctccccaagactgaatgtacgaaactatgtgacgccgccgacgaactcgcgtccttcctcatgcccgccaacgcgtgggccgacctactcagtttcctgtacaagtccatagattccacgtcctccccgccgggattgcaggagtcggcgctcaacatcctggcccggctggcctcccacctcgcggccagcttccccaacctccacgggctcctccacgccgctctctcccacccttcttccgccgatgtgcgcgtcgcggggctcaatgcggccatcagcctcatccagtcccttccttctgccgcggcccgcgaccaatttcaggacctcctcccggccatgatgcgcgctctcgccgagtcactcaactgcgggaacgaaggctcaacccagaaggctctgcaaataatgaacgagctcgct

SEQ ID NO: 22493 - DNA, 527 bp, Zea mays
  Coding DNA Sequence Number=SeqID_8090
ctgccattattgctgtttctttgaagagttgaagaatgccattgaagatttttgacaccacagtagccacctttgatggggtctttgagaaattccgatcagaggctacacaaaacaaggccaacctcattctcttcttggcttataaagacccttccacctctctcagttggtgccctgattgtgttagagctgagcctgtgatctacaagaagctggaggcttcacctggtgatattgcacttttgagagcttatgttggagacagaccaacatggaggaaccctcagcatccatggagggtggaacctaggttcaagctcacaggggtaccaactttgatccgttgggggaatgatgcagtcaaaggtcgcctagaggaccatgaagctcacctcgaacacaaaattgaggctcttgttgctgacaaatgattgccagtgcatcttagatagttggtaataacatgtggtttaaacagtttatggtgtactctttccagcatttggtccctgatgctaggttta

SEQ ID NO: 22494 - DNA, 531 bp, Zea mays
  misc_feature (473)..(473): n is a, c, g, or t
  Coding DNA Sequence Number=SeqID_8091
tgaggttcttaaccgtttcgcttcagccattctgtcaccggaacattccttatggtggttctttacttcgccggatcaaggtctccgtcgccgacaacgctcctctccttccagaagcttctagaaactccgttaaaaacgttatcgtctggactcgccaaggcagtcccctccgcgccatacttgtcatatccgttggggcggttacttctgttgccttgacaggaatgcttgtgtttatgcttttctttctggctgcgaccataaatgctattgtcatatcactgctgatgtctttggcagcagctggaggattcttggctcttttctttgcttttgctactgctatatacattggagcattgtcagtggccatatttgtgatttccgttaccacattttggacaattgtggctattctgataaccacaggctggattggattcttttatactgtgtggctgataactagnaagagcttcgggtttgctaaacactcattgtgcgtgactggctctgcaatttcaactt

SEQ ID NO: 22495 - DNA, 446 bp, Zea mays
  Coding DNA Sequence Number=SeqID_8092
gaacgacgctgagaatgcctggaacgagctgattgcgagaatgaagtccctcattctgcagtctttcgacttgagggtgacgcagtatgaagacgatatcaaagaacgagactcgcagcggaatttaccagggtggaacttttgcacattcttcattctcaaggagggattggctcagggtttcgagagtgttggccttgtggaagatgcccttgttggctatgacgagctcagcctgggcctggatctggcatgcgcagaacaggcagaatctccgacagcgctggcgcttccgcaatacactgaggaactgaggactgctgccgaaaaggccgcaagggatgcgttcggggacattggcgacaaggaggaaacagtcgacctccaatcgcagcccgtagacagccagctgcaggcgctcgcgatcagcgcaacacgaaaaccct

SEQ ID NO: 22496 - DNA, 486 bp, Zea mays
  Coding DNA Sequence Number=SeqID_8093
tagtgggttagccatgccaatgccaagcaaaggaaaggccgtgcaggcagagttcaacctggccactgctaccatctgtataacagccttcgggttagccatgccaatgccaagcaaaggaaaggccgtgcaggcagagttcaacctggccactgctaccatctgtataacagccttcgggatagtcttttggatgactatcaattaccagaaattgtgaggatgccattggaggaactttgcctccagatcaagattttaaagcttggtggcattggctcttttctgagtaaattaatggatatcccagctagagaggcaatatgtctggcaattaaccatcttatggaattgaatgctctagataatcatgaagaattgacccctttggggtttcacttggcacgattaccagtagaaccacacattggcaagatgatcttgtttggagctcttttctgttgtctagatccagttctcaccatt

SEQ ID NO: 22497 - DNA, 426 bp, Zea mays
  misc_feature (256)..(257): n is a, c, g, or t
  misc_feature (384)..(385): n is a, c, g, or t
  misc_feature (397)..(400): n is a, c, g, or t
  Coding DNA Sequence Number=SeqID_8094
gtaactggacgggttcatctagctaacgttatgacaagaggagttgggacatcaactatttgatattgttttacacaagtccgggcctacggaatgttcgtgcaccaaatagacgggggaatggagagatattgggaaaggtgacaaaaccgtatacttttcatttcaaaactagtaagcctgaaatggatggattattttgcgaaaaaatttttgggcctataaaaagtgggatttgcccttgtggaaattatcnngtaatcggagataaaaaaaacgaaccaaaattttgagaacaatgcggagtgaactttgttgattctcgggtacgtaaatatcaaatgggctatataaaactaccatgtacagtacctcatgagtggnntttgaaacgtcnnnntagtcatatcgcgaatcttttaaata

SEQ ID NO: 22498 - DNA, 327 bp, Zea mays
  misc_feature (138)..(141): n is a, c, g, or t
  misc_feature (143)..(143): n is a, c, g, or t
  misc_feature (284)..(286): n is a, c, g, or t
  misc_feature (293)..(294): n is a, c, g, or t
  Coding DNA Sequence Number=SeqID_8095
aggaccggattatacatgttgcagaaaaacctaggggatcagatctgaaagcaatgcatgttgacaccactctcctagggttatctccagaagaagcaaagaaacatccttatattgcatccatgggtgtctatgtgnnnngnactgagaccctgctgaaattattaagatggagctgttcttcttgcaatgactttggatctgaaataatcccatctgctgggagagagcacattgtccaggcatatttgttcaatgactactgggaagatattggaacgatnnngtccttnnttgatgcaaatctggccctatcagaacatcctc

SEQ ID NO: 22499 - DNA, 480 bp, Zea mays
  misc_feature (38)..(43): n is a, c, g, or t
  Coding DNA Sequence Number=SeqID_8096
aaagtcaccgacaatctccagaggtgggttattgaagnnnnnngagctcctgggacactttactccaatgacacctaccagcttcaggtggactttcctgagaattacccaatggaagctccacaggtcatattcttgcatccggctccactgcatccccatatctatagcaacggccatatttgtttagatatattgtatgattcatggtcccctgccatgacagttagttctatctgcattagcattctctcaatgctttcaagctcaactgtaaagcaacgccctgaagataatgaccgctatgtaaagaactgcagaaatggcagatctcccaaggagacaaggtggtggttccatgatgacaaagtataataactggttttctctagtaagtctacaaaactagagtagaggactatccttttgaaagaaatatgaagacttgggaaaaagcattttgagaaaccaggatccctt

SEQ ID NO: 22500 - DNA, 376 bp, Zea mays
  Coding DNA Sequence Number=SeqID_8097
gtgatcaccgccgatctgcacattgcgctgtttttgtcggagtttaaacagattgagaccaccatcatcggcggccgcatcgacgactccagccagtcgtgcattggtgagcacggccggcgcctgctgcgcagtgtcaatccggacattgcgtttgtcagctgtaactcatggagtattgagcgcggtattaccacgccgacggaagacaaagccgggctgaagatggatctgctggccaacgcgcgccggcgcattctgctggccgacagcagtaaatatggctcatggtcgctgtactgcgcggcaccgattgatagcctgaccgatgtggtgaccgattcccgccttgatgaagcggtatgccgtgatttgc

SEQ ID NO: 22501 - DNA, 458 bp, Zea mays
  Coding DNA Sequence Number=SeqID_8098
aggatggcatcgacggcagcgtaccttgcccggcgagcggcgcagaaggagagggtgcggatcttgtaccgccgcgccctcaaagacactctcaactgtgccgtacatcgccacctcttctacgacgacgcttccaacctccgcggaaggttcgagcaaaacagacacgtggaagactttgataccattgataggttgatagaggatgctgaagcaacctacaataagtggcgtcatcctgatccttatattgttccttgggctcctggtggttccaagtttactcgcaacccacctccacctccagggattgagataatttatgattacggccgtgaagataataactgaaacctgattattttttagttttgcccgtcgccataaataaaggtttgcaatcaaattgttctagattactagactgtgaattaaatcacttcatttactcttatgtg

SEQ ID NO: 22502 - DNA, 489 bp, Zea mays
  Coding DNA Sequence Number=SeqID_8099
ttgaagaactcaaccacagcctttggtttggtgaacatgattgagaaccctttgacactgggaccccaattgagctccaaattggtgggaaaagctcaagggttctatgcctccacatcacagagtgaggttgacttgctcatggctatgaactttgccatcactgaaggtaagtacaatggtagcaccatcacaattttggggaggaaccctgttttcaacaaggttagggagatgcctgtgattggtggcagtggtctctttagatttgctagaggctatgctcaacttagaacttattggttctcaccccagacaaaggatgctatagtggagtacaatatttatgttttgcattattgattctattggcactatttttcctcttttgaggccataataagcattcactcgcttgtgatgctcagactttactgttttttatagttgggtttgttctcttcatttaacccacctctatatgcgttt

SEQ ID NO: 22503 - DNA, 312 bp, Zea mays
  Coding DNA Sequence Number=SeqID_8100
tgcagcctcagcaaatatgcagaagcatggtcagcgccacatggagcccatccttcctccatcttctcgacgtatagctatggcccacaaaggcaaggcaacgtctgatgtcacctacaacccggaagacaggcccgaagagtatagcaaccccgctgtctacagccacctcagtgagtatactgccatggcacaagaggttcatgggccagattacgatccgaggaccgaggacatcgacagagatgtcctcatgagggtcagaggatgcaagaggcatgagcgatactggattaccgacagggcaattga

SEQ ID NO: 22504 - DNA, 435 bp, Zea mays
  Coding DNA Sequence Number=SeqID_8101
gaagcgagctgtctcatcatgaccacggagattttacgaagcatgttgtacagaggagctgatctgatccgcgatgtcgagtttgtcatttttgatgaggttcactatgtcaacgattttgagcgtggtgttgtttgggaggaggtcatcatcatgttaccacaacatatctcactgatcctattgtctgccactgtaccgaatacctacgagttcgcctcttgggttggcaggacaaaacaaaaggatatctatgtcatttcaacaccgaagagacctgtcccactcgaacactacttgtgggcaggtaaagacacctacaagatcgtcgactcggaaaagaagtttgttgagaagggttggaaggacgctcatcaggctgtcacgaggaaggataccgccaaagccgcagatacaacagtggctacccgcgga

SEQ ID NO: 22505 - DNA, 488 bp, Zea mays
  Coding DNA Sequence Number=SeqID_8102
aacgcttcttagtcctcacttagtgggttacaggctgcccaggtggctcagcggtaaagaatccacccgccaatgcaggagattgggcaagcctggctgaactgagaactgcagaagcaaggcagatggcttgtgatgaactggtcacaaatgaagaagaggagtacagcctctatgaagctgtcaaattcctaatgctgaacagagccattgaactctatgacgataaggagaagggaagggaagtgccgtttttctctgtgcttctctttgctcgggatacgtcaagtgaccctggtcagctgctgcggaaccatctgaaccaggtggggcacactggcggcctggagcaggtcgagatgttcctcctggcctacgctgtgcgccacaccatccaggtgtatcggctctccaagtatggcactgaggagttcgtcacggtctaccccaccgacgccccccgggactggccagtggtgaccctgatc

SEQ ID NO: 22506 - DNA, 405 bp, Zea mays
  Coding DNA Sequence Number=SeqID_8103
ggccagcgcactgcttgctgtgctggcggccaatgcactcgtcctctttctgatctgccccgaggccaacggggccgtagctggctgggcgggcgaggcccggatgctggcgccccgttccatgatcgtggtggtcaaccacgtgcgttgctaccaggtgatggcggcaccgaagcccgggccgatggtcgacggcgatcaggttcccgacctgcgcgacgtgcgcggccaggacagcgcctagctggccctggagatcgccgtggccggaggccacaacctgctgttcatcggcccgccggggtcggacaagtcgatgctggctccagcgcctgcccggactcctgccgacgatgtctccggccgagctgctggagacctccatggtgcattcggtggccggcc

SEQ ID NO: 22507 - DNA, 518 bp, Zea mays
  Coding DNA Sequence Number=SeqID_8104
gttctgaattcctatgacgtgctctggctcgcattgaacacactgatggcaagcgatatttcacatgggaccgttccacattcccggatccagaggagatgcagcggaagatagcagataaggggaggaagatggtaactattgtagacccacatatgaagagggacagtgggtaccacatccatgaggaagctactgccaaaggttactatgttaaagatgcaagcgggaaggactacgatgggtggtgctggcctgggtcatcatcatatcctgacatgttgaatcctgaaatacgggactggtgggctgacaagttctcctatcaaaactacaagggatcaactccaacgctgtacatttggaacgacatgaacgagccatcagttttcaacggccctgaggtcaccatgcctagggatgcattacataacggtgatgttgaacatcgagaactgcacaatgcatatgggtactacttccatatggctacatcagatgggcttctcaagcgaggt
